United States Patent Application Publication US 2003/0109690 A1 - sequence listing, part 3

SEQ ID NO: 8545 - protein, 33 aa, Homo sapiens
  MISC_FEATURE (3): Xaa equals any of the naturally occurring L-amino acids
  MISC_FEATURE (9): Xaa equals any of the naturally occurring L-amino acids
  MISC_FEATURE (15): Xaa equals any of the naturally occurring L-amino acids
  MISC_FEATURE (26): Xaa equals any of the naturally occurring L-amino acids
  MISC_FEATURE (27): Xaa equals any of the naturally occurring L-amino acids
GKXPGTSWXKGPPFXGKTGPRKKGRXXRAATKP

SEQ ID NO: 8546 - protein, 34 aa, Homo sapiens
  MISC_FEATURE (8): Xaa equals any of the naturally occurring L-amino acids
  MISC_FEATURE (27): Xaa equals any of the naturally occurring L-amino acids
  MISC_FEATURE (29): Xaa equals any of the naturally occurring L-amino acids
  MISC_FEATURE (30): Xaa equals any of the naturally occurring L-amino acids
CLIAWLPXISTIIFLGKFSFFCKPTSXDXXNHFL

SEQ ID NO: 8547 - protein, 15 aa, Homo sapiens
  MISC_FEATURE (4): Xaa equals any of the naturally occurring L-amino acids
  MISC_FEATURE (5): Xaa equals any of the naturally occurring L-amino acids
SAAXXSRQSATIEAA

SEQ ID NO: 8548 - protein, 81 aa, Homo sapiens
  MISC_FEATURE (10): Xaa equals any of the naturally occurring L-amino acids
  MISC_FEATURE (39): Xaa equals any of the naturally occurring L-amino acids
  MISC_FEATURE (46): Xaa equals any of the naturally occurring L-amino acids
  MISC_FEATURE (54): Xaa equals any of the naturally occurring L-amino acids
  MISC_FEATURE (64): Xaa equals any of the naturally occurring L-amino acids
  MISC_FEATURE (67): Xaa equals any of the naturally occurring L-amino acids
  MISC_FEATURE (76): Xaa equals any of the naturally occurring L-amino acids
APFPYLSLLXSPGLPLMTSPLPSTDLIFNSATPSSNPLXFPILLLXCIEGSMHXGVSSGFRGPXHPXATLDLCPPXPQSPH

SEQ ID NO: 8549 - protein, 37 aa, Homo sapiens
  MISC_FEATURE (7): Xaa equals any of the naturally occurring L-amino acids
  MISC_FEATURE (8): Xaa equals any of the naturally occurring L-amino acids
  MISC_FEATURE (20): Xaa equals any of the naturally occurring L-amino acids
RQIHSTXXVRDPWAYRVFPXQCAEWKPLPDPFPNWSC

SEQ ID NO: 8550 - protein, 93 aa, Homo sapiens
TKYPPIKKVINWVTEAEITIYVLQYPAAHPNMEAGPPESGESTDALKLCPHEEFLRLCKERAEEIYPIKERNNRTRLALIICNTEFDHLPPRN

SEQ ID NO: 8551 - protein, 120 aa, Homo sapiens
  MISC_FEATURE (105): Xaa equals any of the naturally occurring L-amino acids
VCGAEEGCGCCLHEQVELEAKVDALNDEINFLRTLNETELTELQSQISDTSVVLSMDNSRSLDLDGIIAEVKAQYEEMAKCSRAEAEAWYQTKFETLQAQAGKHXDDLRNTRNEISEMNR

SEQ ID NO: 8552 - protein, 72 aa, Homo sapiens
  MISC_FEATURE (14): Xaa equals any of the naturally occurring L-amino acids
  MISC_FEATURE (37): Xaa equals any of the naturally occurring L-amino acids
  MISC_FEATURE (41): Xaa equals any of the naturally occurring L-amino acids
  MISC_FEATURE (46): Xaa equals any of the naturally occurring L-amino acids
  MISC_FEATURE (47): Xaa equals any of the naturally occurring L-amino acids
  MISC_FEATURE (51): Xaa equals any of the naturally occurring L-amino acids
  MISC_FEATURE (56): Xaa equals any of the naturally occurring L-amino acids
  MISC_FEATURE (59): Xaa equals any of the naturally occurring L-amino acids
  MISC_FEATURE (65): Xaa equals any of the naturally occurring L-amino acids
  MISC_FEATURE (69): Xaa equals any of the naturally occurring L-amino acids
  MISC_FEATURE (71): Xaa equals any of the naturally occurring L-amino acids
LPLSKLTLTKGNKXWSSTAVAAALELVDPPGCKEIRXNSQXTAKVXXTPPXIPSYXGPXESSCSXNQAXFXP

SEQ ID NO: 8553 - protein, 35 aa, Homo sapiens
  MISC_FEATURE (2): Xaa equals any of the naturally occurring L-amino acids
  MISC_FEATURE (3): Xaa equals any of the naturally occurring L-amino acids
AXXTKGNKSWSSTAVAAALELVDPPGCRNSARVPF

SEQ ID NO: 8554 - protein, 87 aa, Homo sapiens
  MISC_FEATURE (22): Xaa equals any of the naturally occurring L-amino acids
  MISC_FEATURE (67): Xaa equals any of the naturally occurring L-amino acids
VMKVWDAHVTAVCSQDASELVXKLGADDVIDYKSGSVEEQLKSLKPFDFILDNVGGSTETWAPDFLXKWSGATYVTLVTPFLLNMDR

SEQ ID NO: 8555 - protein, 53 aa, Homo sapiens
  MISC_FEATURE (2): Xaa equals any of the naturally occurring L-amino acids
  MISC_FEATURE (4): Xaa equals any of the naturally occurring L-amino acids
VXLXINMLAFIPVLTKKINPRSTEAAIKYFLTQATASIILLIAILFNNILSGQ

SEQ ID NO: 8556 - protein, 92 aa, Homo sapiens
  MISC_FEATURE (11): Xaa equals any of the naturally occurring L-amino acids
  MISC_FEATURE (24): Xaa equals any of the naturally occurring L-amino acids
  MISC_FEATURE (31): Xaa equals any of the naturally occurring L-amino acids
  MISC_FEATURE (34): Xaa equals any of the naturally occurring L-amino acids
  MISC_FEATURE (35): Xaa equals any of the naturally occurring L-amino acids
  MISC_FEATURE (58): Xaa equals any of the naturally occurring L-amino acids
  MISC_FEATURE (67): Xaa equals any of the naturally occurring L-amino acids
  MISC_FEATURE (83): Xaa equals any of the naturally occurring L-amino acids
  MISC_FEATURE (85): Xaa equals any of the naturally occurring L-amino acids
INMLAFIPVLXKKINPRSTEAAIXLFPHASXRIXXPSNGYPLQQYTLRNNETITNTTXQYSSLDKHXGYWQLKLGIAPLSLLXPXRLPQGTP

SEQ ID NO: 8557 - protein, 53 aa, Homo sapiens; identical to SEQ ID NO: 6848

SEQ ID NO: 8558 - protein, 179 aa, Homo sapiens
  MISC_FEATURE (160): Xaa equals any of the naturally occurring L-amino acids
  MISC_FEATURE (175): Xaa equals any of the naturally occurring L-amino acids
  MISC_FEATURE (178): Xaa equals any of the naturally occurring L-amino acids
VNIAHQISLRSEAFFHAMTSQHELQDYLRKTSQAVKMLRDKIAQIDKVMCEGSLHILRLALTRNNCVKVYNKLKLMATVHQTQPTVQVLLSTSEFVGALDLIATTQEVLQQELQGIHSFRHLGSQLCELEKLIDKMMIAEFSTYSHSDLNRPLEDDCQVXKEERLISLGFGFKTXKAXF

SEQ ID NO: 8559 - protein, 165 aa, Homo sapiens
EEHPLSLGDQVTPIIDLMAISNAHFAKLRDFITLRLPPGFPVKIEIPLFHVLNARITFSNLCGCDEPLSSVWVPAPSSAVAASGNPFPCEVDPTVFEVPNGYSVLGMERNEPLRDEDDDLLQFAIQQSLLEAGTEAEQVGLAQGVGSGLCRHTAEVTAVGSGGCR

SEQ ID NO: 8560 - protein, 43 aa, Homo sapiens
  MISC_FEATURE (15): Xaa equals any of the naturally occurring L-amino acids
  MISC_FEATURE (18): Xaa equals any of the naturally occurring L-amino acids
  MISC_FEATURE (25): Xaa equals any of the naturally occurring L-amino acids
  MISC_FEATURE (39): Xaa equals any of the naturally occurring L-amino acids
IGGITAPTVRQYYAXLTXTQCKPVXTQCWVFGVIGFLGXPLFA

SEQ ID NO: 8561 - protein, 120 aa, Homo sapiens
  MISC_FEATURE (99): Xaa equals any of the naturally occurring L-amino acids
  MISC_FEATURE (112): Xaa equals any of the naturally occurring L-amino acids
QKICLIQHERCHTGKTPFVCTECGKSYSHKYGLITHQRIHTGEKPYECNECGKAFTTKSVLNVHQRTHTGERPYGCSDCEKAFSHLSNLVKHKKMHTRXMGRISQVENSCNXESQLLPYK

SEQ ID NO: 8562 - protein, 155 aa, Homo sapiens
  MISC_FEATURE (19): Xaa equals any of the naturally occurring L-amino acids
WIPRAAGIRHEVSGAIRAXPDGTSWSCEGTQGQEKMMMMGPKEEEQSCEYETRLPGNHSTSQEIFRQRFRHLRYQETPGPREALSQLRVLCCEWLRPEKHTKEQILEFLVLEQFLTILPEELQSWVRGHHPKSGEEAVTVLEDLEKGLEPEPQSQ

SEQ ID NO: 8563 - protein, 43 aa, Homo sapiens
  MISC_FEATURE (10): Xaa equals any of the naturally occurring L-amino acids
VWEGLQETAXASQCIKGSTQVKPHYECDECGKAYISHSSLIQS

SEQ ID NO: 8564 - protein, 68 aa, Homo sapiens
PILPLSTLKAWSGAALTVHLLFRPQIALSPSDPLSCRPGNACCQHRPLPGSSGQPGAGVLRKPPPQAL
